United States Patent Application Publication US 2024/0052049 A1 - sequence listing, part 2

SEQ ID NO: 3661 - protein, 3684 aa, Homo sapiens
MLWWEEVEDCYEREDVQKKTFTKWVNAQFSKFGKQHIENLFSDLQDGRRLLDLLEGLTGQKLPKEKGSTRVHALNNVNKALRVLQNNNVDLVNIGSTDIVDGNHKLTLGLIWNIILHWQVKNVMKNIMAGLQQTNSEKILLSWVRQSTRNYPQVNVINFTTSWSDGLALNALIHSHRPDLFDWNSVVCQQSATQRLEHAFNIARYQLGIEKLLDPEDVDTTYPDKKSILMYITSLFQVLPQQVSIEAIQEVEMLPRPPKVTKEEHFQLHHQMHYSQQITVSLAQGYERTSSPKPRFKSYAYTQAAYVTTSDPTRSPFPSQHLEAPEDKSFGSSLMESEVNLDRYQTALEEVLSWLLSAEDTLQAQGEISNDVEVVKDQFHTHEGYMMDLTAHQGRVGNILQLGSKLIGTGKLSEDEETEVQEQMNLLNSRWECLRVASMEKQSNLHRVLMDLQNQKLKELNDWLTKTEERTRKMEEEPLGPDLEDLKRQVQQHKVLQEDLEQEQVRVNSLTHMVVVVDESSGDHATAALEEQLKVLGDRWANICRWTEDRWVLLQDILLKWQRLTEEQCLFSAWLSEKEDAVNKIHTTGFKDQNEMLSSLQKLAVLKADLEKKKQSMGKLYSLKQDLLSTLKNKSVTQKTEAWLDNFARCWDNLVQKLEKSTAQISQAVTTTQPSLTQTTVMETVTTVTTREQILVKHAQEELPPPPPQKKRQITVDSEIRKRLDVDITELHSWITRSEAVLQSPEFAIFRKEGNFSDLKEKVNAIEREKAEKFRKLQDASRSAQALVEQMVNEGVNADSIKQASEQLNSRWIEFCQLLSERLNWLEYQNNIIAFYNQLQQLEQMTTTAENWLKIQPTTPSEPTAIKSQLKICKDEVNRLSDLQPQIERLKIQSIALKEKGQGPMFLDADFVAFTNHFKQVFSDVQAREKELQTIFDTLPPMRYQETMSAIRTWVQQSETKLSIPQLSVTDYEIMEQRLGELQALQSSLQEQQSGLYYLSTTVKEMSKKAPSEISRKYQEFEEIEGRWKKLSSQLVEHCQKLEEQMNKLRKIQNHIQTLKKWMAEVDVFLKEEWPALGDSEILKKQLKQCRLLVSDIQTIQPSLNSVNEGGQKIKNEAEPEFASRLETELKELNTQWDHMCQQVYARKEALKGGLEKTVSLQKDLSEMHEWMTQAEEEYLERDFEYKTPDELQKAVEEMKRAKEEAQQKEAKVKLLTESVNSVIAQAPPVAQEALKKELETLTTNYQWLCTRLNGKCKTLEEVWACWHELLSYLEKANKWLNEVEFKLKTTENIPGGAEEISEVLDSLENLMRHSEDNPNQIRILAQTLTDGGVMDELINEELETFNSRWRELHEEAVRRQKLLEQSIQSAQETEKSLHLIQESLTFIDKQLAAYIADKVDAAQMPQEAQKIQSDLTSHEISLEEMKKHNQGKEAAQRVLSQIDVAQKKLQDVSMKFRLFQKPANFEQRLQESKMILDEVKMHLPALETKSVEQEVVQSQLNHCVNLYKSLSEVKSEVEMVIKTGRQIVQKKQTENPKELDERVTALKLHYNELGAKVTERKQQLEKCLKLSRKMRKEMNVLTEWLAATDMELTKRSAVEGMPSNLDSEVAWGKATQKEIEKQKVHLKSITEVGEALKTVLGKKETLVEDKLSLLNSNWIAVTSRAEEWLNLLLEYQKHMETFDQNVDHITKWIIQADTLLDESEKKKPQQKEDVLKRLKAELNDIRPKVDSTRDQAANLMANRGDHCRKLVEPQISELNHRFAAISHRIKTGKASIPLKELEQFNSDIQKLLEPLEAEIQQGVNLKEEDFNKDMNEDNEGTVKELLQRGDNLQQRITDERKREEIKIKQQLLQTKHNALKDLRSQRRKKALEISHQWYQYKRQADDLLKCLDDIEKKLASLPEPRDERKIKEIDRELQKKKEELNAVRRQAEGLSEDGAAMAVEPTQIQLSKRWREIESKFAQFRRLNFAQIHTVREETMMVMTEDMPLEISYVPSTYLTEITHVSQALLEVEQLLNAPDLCAKDFEDLFKQEESLKNIKDSLQQSSGRIDIIHSKKTAALQSATPVERVKLQEALSQLDFQWEKVNKMYKDRQGRFDRSVEKWRRFHYDIKIFNQWLTEAEQFLRKTQIPENWEHAKYKWYLKELQDGIGQRQTVVRTLNATGEEIIQQSSKTDASILQEKLGSLNLRWQEVCKQLSDRKKRLEEQKNILSEFQRDLNEFVLWLEEADNIASIPLEPGKEQQLKEKLEQVKLLVEELPLRQGILKQLNETGGPVLVSAPISPEEQDKLENKLKQTNLQWIKVSRALPEKQGEIEAQIKDLGQLEKKLEDLEEQLNHLLLWLSPIRNQLEIYNQPNQEGPFDVKETEIAVQAKQPDVEEILSKGQHLYKEKPATQPVKRKLEDLSSEWKAVNRLLQELRAKQPDLAPGLTTIGASPTQTVTLVTQPVVTKETAISKLEMPSSLMLEVPALADFNRAWTELTDWLSLLDQVIKSQRVMVGDLEDINEMIIKQKATMQDLEQRRPQLEELITAAQNLKNKTSNQEARTIITDRIERIQNQWDEVQEHLQNRRQQLNEMLKDSTQWLEAKEEAEQVLGQARAKLESWKEGPYTVDAIQKKITETKQLAKDLRQWQTNVDVANDLALKLLRDYSADDTRKVHMITENINASWRSIHKRVSEREAALEETHRLLQQFPLDLEKFLAWLTEAETTANVLQDATRKERLLEDSKGVKELMKQWQDLQGEIEAHTDVYHNLDENSQKILRSLEGSDDAVLLQRRLDNMNFKWSELRKKSLNIRSHLEASSDQWKRLHLSLQELLVWLQLKDDELSRQAPIGGDFPAVQKQNDVHRAFKRELKTKEPVIMSTLETVRIFLTEQPLEGLEKLYQEPRELPPEERAQNVTRLLRKQAEEVNTEWEKLNLHSADWQRKIDETLERLQELQEATDELDLKLRQAEVIKGSWQPVGDLLIDSLQDHLEKVKALRGEIAPLKENVSHVNDLARQLTTLGIQLSPYNLSTLEDLNTRWKLLQVAVEDRVRQLHEAHRDFGPASQHFLSTSVQGPWERAISPNKVPYYINHETQTTCWDHPKMTELYQSLADLNNVRFSAYRTAMKLRRLQKALCLDLLSLSAACDALDQHNLKQNDQPMDILQIINCLTTIYDRLEQEHNNLVNVPLCVDMCLNWLLNVYDTGRTGRIRVLSFKTGIISLCKAHLEDKYRYLFKQVASSTGFCDQRRLGLLLHDSIQIPRQLGEVASFGGSNIEPSVRSCFQFANNKPEIEAALFLDWMRLEPQSMVWLPVLHRVAAAETAKHQAKCNICKECPIIGFRYRSLKHFNYDICQSCFFSGRVAKGHKMHYPMVEYCTPTTSGEDVRDFAKVLKNKFRTKRYFAKHPRMGYLPVQTVLEGDNMETPVTLINFWPVDSAPASSPQLSHDDTHSRIEHYASRLAEMENSNGSYLNDSISPNESIDDEHLLIQHYCQSLNQDSPLSQPRSPAQILISLESEERGELERILADLEEENRNLQAEYDRLKQQHEHKGLSPLPSPPEMMPTSPQSPRDAELIAEAKLLRQHKGRLEARMQILEDHNKQLESQLHRLRQLLEQPQAEAKVNGTTVSSPSTSLQRSDSSQPMLLRVVGSQTSDSMGEEDLLSPPQDTSTGLEEVMEQLNNSFPSSRGRNTPGKPMREDTM

SEQ ID NO: 3662 - protein, 3121 aa, Homo sapiens
MPGAAGVLLLLLLSGGLGGVQAQRPQQQRQSQAHQQRGLFPAVLNLASNALITTNATCGEKGPEMYCKLVEHVPGQPVRNPQCRICNQNSSNPNQRHPITNAIDGKNTWWQSPSIKNGIEYHYVTITLDLQQVFQIAYVIVKAANSPRPGNWILERSLDDVEYKPWQYHAVTDTECLTLYNIYPRTGPPSYAKDDEVICTSFYSKIHPLENGEIHISLINGRPSADDPSPELLEFTSARYIRLRFQRIRTLNADLMMFAHKDPREIDPIVTRRYYYSVKDISVGGMCICYGHARACPLDPATNKSRCECEHNTCGDSCDQCCPGFHQKPWRAGTFLTKTECEACNCHGKAEECYYDENVARRNLSLNIRGKYIGGGVCINCTQNTAGINCETCTDGFFRPKGVSPNYPRPCQPCHCDPIGSLNEVCVKDEKHARRGLAPGSCHCKTGFGGVSCDRCARGYTGYPDCKACNCSGLGSKNEDPCFGPCICKENVEGGDCSRCKSGFFNLQEDNWKGCDECFCSGVSNRCQSSYWTYGKIQDMSGWYLTDLPGRIRVAPQQDDLDSPQQISISNAEARQALPHSYYWSAPAPYLGNKLPAVGGQLTFTISYDLEEEEEDTERVLQLMIILEGNDLSISTAQDEVYLHPSEEHTNVLLLKEESFTIHGTHFPVRRKEFMTVLANLKRVLLQITYSFGMDAIFRLSSVNLESAVSYPTDGSIAAAVEVCQCPPGYTGSSCESCWPRHRRVNGTIFGGICEPCQCFGHAESCDDVTGECLNCKDHTGGPYCDKCLPGFYGEPTKGTSEDCQPCACPLNIPSNNFSPTCHLDRSLGLICDGCPVGYTGPRCERCAEGYFGQPSVPGGSCQPCQCNDNLDFSIPGSCDSLSGSCLICKPGTTGRYCELCADGYFGDAVDAKNCQPCRCNAGGSFSEVCHSQTGQCECRANVQGQRCDKCKAGTFGLQSARGCVPCNCNSFGSKSFDCEESGQCWCQPGVTGKKCDRCAHGYFNFQEGGCTACECSHLGNNCDPKTGRCICPPNTIGEKCSKCAPNTWGHSITTGCKACNCSTVGSLDFQCNVNTGQCNCHPKFSGAKCTECSRGHWNYPRCNLCDCFLPGTDATTCDSETKKCSCSDQTGQCTCKVNVEGIHCDRCRPGKFGLDAKNPLGCSSCYCFGTTTQCSEAKGLIRTWVTLKAEQTILPLVDEALQHTTTKGIVFQHPEIVAHMDLMREDLHLEPFYWKLPEQFEGKKLMAYGGKLKYAIYFEAREETGFSTYNPQVIIRGGTPTHARIIVRHMAAPLIGQLTRHEIEMTEKEWKYYGDDPRVHRTVTREDFLDILYDIHYILIKATYGNFMRQSRISEISMEVAEQGRGTTMTPPADLIEKCDCPLGYSGLSCEACLPGFYRLRSQPGGRTPGPTLGTCVPCQCNGHSSLCDPETSICQNCQHHTAGDFCERCALGYYGIVKGLPNDCQQCACPLISSSNNFSPSCVAEGLDDYRCTACPRGYEGQYCERCAPGYTGSPGNPGGSCQECECDPYGSLPVPCDPVTGFCTCRPGATGRKCDGCKHWAREGWECVFCGDECTGLLLGDLARLEQMVMSINLTGPLPAPYKMLYGLENMTQELKHLLSPQRAPERLIQLAEGNLNTLVTEMNELLTRATKVTADGEQTGQDAERTNTRAKSLGEFIKELARDAEAVNEKAIKLNETLGTRDEAFERNLEGLQKEIDQMIKELRRKNLETQKEIAEDELVAAEALLKKVKKLFGESRGENEEMEKDLREKLADYKNKVDDAWDLLREATDKIREANRLFAVNQKNMTALEKKKEAVESGKRQIENTLKEGNDILDEANRLADEINSIIDYVEDIQTKLPPMSEELNDKIDDLSQEIKDRKLAEKVSQAESHAAQLNDSSAVLDGILDEAKNISFNATAAFKAYSNIKDYIDEAEKVAKEAKDLAHEATKLATGPRGLLKEDAKGCLQKSFRILNEAKKLANDVKENEDHLNGLKTRIENADARNGDLLRTLNDTLGKLSAIPNDTAAKLQAVKDKARQANDTAKDVLAQITELHQNLDGLKKNYNKLADSVAKTNAVVKDPSKNKIIADADATVKNLEQEADRLIDKLKPIKELEDNLKKNISEIKELINQARKQANSIKVSVSSGGDCIRTYKPEIKKGSYNNIVVNVKTAVADNLLFYLGSAKFIDFLAIEMRKGKVSFLWDVGSGVGRVEYPDLTIDDSYWYRIVASRTGRNGTISVRALDGPKASIVPSTHHSTSPPGYTILDVDANAMLFVGGLTGKLKKADAVRVITFTGCMGETYFDNKPIGLWNFREKEGDCKGCTVSPQVEDSEGTIQFDGEGYALVSRPIRWYPNISTVMFKFRTFSSSALLMYLATRDLRDFMSVELTDGHIKVSYDLGSGMASVVSNQNHNDGKWKSFTLSRIQKQANISIVDIDTNQEENIATSSSGNNFGLDLKADDKIYFGGLPTLRNLSMKARPEVNLKKYSGCLKDIEISRTPYNILSSPDYVGVTKGCSLENVYTVSFPKPGFVELSPVPIDVGTEINLSFSTKNESGIILLGSGGTPAPPRRKRRQTGQAYYAILLNRGRLEVHLSTGARTMRKIVIRPEPNLFHDGREHSVHVERTRGIFTVQVDENRRYMQNLTVEQPIEVKKLFVGGAPPEFQPSPLRNIPPFEGCIWNLVINSVPMDFARPVSFKNADIGRCAHQKLREDEDGAAPAEIVIQPEPVPTPAFPTPTPVLTHGPCAAESEPALLIGSKQFGLSRNSHIAIAFDDTKVKNRLTIELEVRTEAESGLLFYMARINHADFATVQLRNGLPYFSYDLGSGDTHTMIPTKINDGQWHKIKIMRSKQEGILYVDGASNRTISPKKADILDVVGMLYVGGLPINYTTRRIGPVTYSIDGCVRNLHMAEAPADLEQPTSSFHVGTCFANAQRGTYFDGTGFAKAVGGFKVGLDLLVEFEFRTTTTTGVLLGISSQKMDGMGIEMIDEKLMFHVDNGAGRFTAVYDAGVPGHLCDGQWHKVTANKIKHRIELTVDGNQVEAQSPNPASTSADTNDPVFVGGFPDDLKQFGLTTSIPFRGCIRSLKLTKGTGKPLEVNFAKALELRGVQPVSCPAN

SEQ ID NO: 3663 - protein, 474 aa, Homo sapiens
MRLSKTLVDMDMADYSAALDPAYTTLEFENVQVLTMGNDTSPSEGTNLNAPNSLGVSALCAICGDRATGKHYGASSCDGCKGFFRRSVRKNHMYSCRFSRQCVVDKDKRNQCRYCRLKKCFRAGMKKEAVQNERDRISTRRSSYEDSSLPSINALLQAEVLSRQITSPVSGINGDIRAKKIASIADVCESMKEQLLVLVEWAKYIPAFCELPLDDQVALLRAHAGEHLLLGATKRSMVFKDVLLLGNDYIVPRHCPELAEMSRVSIRILDELVLPFQELQIDDNEYAYLKAIIFFDPDAKGLSDPGKIKRLRSQVQVSLEDYINDRQYDSRGRFGELLLLLPTLQSITWQMIEQIQFIKLFGMAKIDNLLQEMLLGGSPSDAPHAHHPLHPHLMQEHMGTNVIVANTMPTHLSNGQMCEWPRPRGQAATPETPQPSPPGGSGSEPYKLLPGAVATIVKPLSAIPQPTITKQEVI

SEQ ID NO: 3664 - RNA, 40 nt, Artificial Sequence
  Description of Artificial Sequence: Synthetic polynucleotide
acucacuauuuguuuucgcgcccaguugcaaaaagugucg

SEQ ID NO: 3665 - RNA, 39 nt, Artificial Sequence
  Description of Artificial Sequence: Synthetic polynucleotide
gccagagcaacaaccuuccgagccgcgggauaaaccgag

SEQ ID NO: 3666 - RNA, 40 nt, Artificial Sequence
  Description of Artificial Sequence: Synthetic polynucleotide
ggggaccgcgccccacaugugagugaggccgaaacguaga

SEQ ID NO: 3667 - DNA, 30 bp, Artificial Sequence
  Description of Artificial Sequence: Synthetic oligonucleotide
tataattctaccctattgaggcattgacta

SEQ ID NO: 3668 - protein, 493 aa, Artificial Sequence
  Description of Artificial Sequence: Synthetic polypeptide
MALPVTALLLPLALLLHAARPDIVLTQSPASLAVSLGERATINCRASESVSVIGAHLIHWYQQKPGQPPKLLIYLASNLETGVPARFSGSGSGTDFTLTISSLQAEDAAIYYCLQSRIFPRTFGQGTKLEIKGSTSGSGKPGSGEGSTKGQVQLVQSGSELKKPGASVKVSCKASGYTFTDYSINWVRQAPGQGLEWMGWINTETREPAYAYDFRGRFVFSLDTSVSTAYLQISSLKAEDTAVYYCARDYSYAMDYWGQGTLVTVSSAAATTTPAPRPPTPAPTIASQPLSLRPEACRPAAGGAVHTRGLDFACDIYIWAPLAGTCGVLLLSLVITLYCKRGRKKLLYIFKQPFMRPVQTTQEEDGCSCRFPEEEEGGCELRVKFSRSADAPAYQQGQNQLYNELNLGRREEYDVLDKRRGRDPEMGGKPRRKNPQEGLYNELQKDKMAEAYSEIGMKGERRRGKGHDGLYQGLSTATKDTYDALHMQALPPR

SEQ ID NO: 3669 - protein, 207 aa, Artificial Sequence
  Description of Artificial Sequence: Synthetic polypeptide
KNQVEQSPQSLIILEGKNCTLQCNYTVSPFSNLRWYKQDTGRGPVSLTIMTFSENTKSNGRYTATLDADTKQSSLHITASQLSDSASYICVVNHSGGSYIPTFGRGTSLIVHPYIQKPDPAVYQLRDSKSSDKSVCLFTDFDSQTNVSQSKDSDVYITDKTVLDMRSMDFKSNSAVAWSNKSDFACANAFNNSIIPEDTFFPSPESS

SEQ ID NO: 3670 - protein, 246 aa, Artificial Sequence
  Description of Artificial Sequence: Synthetic polypeptide
DVKVTQSSRYLVKRTGEKVFLECVQDMDHENMFWYRQDPGLGLRLIYFSYDVKMKEKGDIPEGYSVSREKKERFSLILESASTNQTSMYLCASSFLMTSGDPYEQYFGPGTRLTVTEDLKNVFPPEVAVFEPSEAEISHTQKATLVCLATGFYPDHVELSWWVNGKEVHSGVSTDPQPLKEQPALNDSRYCLSSRLRVSATFWQNPRNHFRCQVQFYGLSENDEWTQDRAKPVTQIVSAEAWGRAD

SEQ ID NO: 3671 - protein, 115 aa, Artificial Sequence
  Description of Artificial Sequence: Synthetic polypeptide
MQEVTQIPAALSVPEGENLVLNCSFTDSAIYNLQWFRQDPGKGLTSLLLIQSSQREQTSGRLNASLDKSSGRSTLYIAASQPGDSATYLCAVRPTSGGSYIPTFGRGTSLIVHPY

SEQ ID NO: 3672 - protein, 112 aa, Artificial Sequence
  Description of Artificial Sequence: Synthetic polypeptide
MGVTQTPKFQVLKTGQSMTLQCAQDMNHEYMSWYRQDPGMGLRLIHYSVGAGITDQGEVPNGYNVSRSTTEDFPLRLLSAAPSQTSVYFCASSYVGNTGELFFGEGSRLTVL

SEQ ID NO: 3673 - protein, 166 aa, Artificial Sequence
  Description of Artificial Sequence: Synthetic polypeptide
APPRLICDSRVLERYLLEAKEAENITTGCAEHCSLNENITVPDTKVNFYAWKRMEVGQQAVEVWQGLALLSEAVLRGQALLVNSSQPWEPLQLHVDKAVSGLRSLTTLLRALGAQKEAISPPDAASAAPLRTITADTFRKLFRVYSNFLRGKLKLYTGEACRTGDR

SEQ ID NO: 3674 - protein, 452 aa, Artificial Sequence; identical to SEQ ID NO: 3655
  Description of Artificial Sequence: Synthetic polypeptide

SEQ ID NO: 3675 - protein, 1462 aa, Artificial Sequence
  Description of Artificial Sequence: Synthetic polypeptide
LSVKAQTAHIVLEDGTKMKGYSFGHPSSVAGEVVFNTGLGGYPEAITDPAYKGQILTMANPIIGNGGAPDTTALDELGLSKYLESNGIKVSGLLVLDYSKDYNHWLATKSLGQWLQEEKVPAIYGVDTRMLTKIIRDKGTMLGKIEFEGQPVDFVDPNKQNLIAEVSTKDVKVYGKGNPTKVVAVDCGIKNNVIRLLVKRGAEVHLVPWNHDFTKMEYDGILIAGGPGNPALAEPLIQNVRKILESDRKEPLFGISTGNLITGLAAGAKTYKMSMANRGQNQPVLNITNKQAFITAQNHGYALDNTLPAGWKPLFVNVNDQTNEGIMHESKPFFAVQFHPEVTPGPIDTEYLFDSFFSLIKKGKATTITSVLPKPALVASRVEVSKVLILGSGGLSIGQAGEFDYSGSQAVKAMKEENVKTVLMNPNIASVQTNEVGLKQADTVYFLPITPQFVTEVIKAEQPDGLILGMGGQTALNCGVELFKRGVLKEYGVKVLGTSVESIMATEDRQLFSDKLNEINEKIAPSFAVESIEDALKAADTIGYPVMIRSAYALGGLGSGICPNRETLMDLSTKAFAMTNQILVEKSVTGWKEIEYEVVRDADDNCVTVCNMENVDAMGVHTGDSVVVAPAQTLSNAEFQMLRRTSINVVRHLGIVGECNIQFALHPTSMEYCIIEVNARLSRSSALASKATGYPLAFIAAKIALGIPLPEIKNVVSGKTSACFEPSLDYMVTKIPRWDLDRFHGTSSRIGSSMKSVGEVMAIGRTFEESFQKALRMCHPSIEGFTPRLPMNKEWPSNLDLRKELSEPSSTRIYAIAKAIDDNMSLDEIEKLTYIDKWFLYKMRDILNMEKTLKGLNSESMTEETLKRAKEIGFSDKQISKCLGLTEAQTRELRLKKNIHPWVKQIDTLAAEYPSVTNYLYVTYNGQEHDVNFDDHGMMVLGCGPYHIGSSVEFDWCAVSSIRTLRQLGKKTVVVNCNPETVSTDFDECDKLYFEELSLERILDIYHQEACGGCIISVGGQIPNNLAVPLYKNGVKIMGTSPLQIDRAEDRSIFSAVLDELKVAQAPWKAVNTLNEALEFAKSVDYPCLLRPSYVLSGSAMNVVFSEDEMKKFLEEATRVSQEHPVVLTKFVEGAREVEMDAVGKDGRVISHAISEHVEDAGVHSGDATLMLPTQTISQGAIEKVKDATRKIAKAFAISGPFNVQFLVKGNDVLVIECNLRASRSFPFVSKTLGVDFIDVATKVMIGENVDEKHLPTLDHPIIPADYVAIKAPMFSWPRLRDADPILRCEMASTGEVACFGEGIHTAFLKAMLSTGFKIPQKGILIGIQQSFRPRFLGVAEQLHNEGFKLFATEATSDWLNANNVPATPVAWPSQEGQNPSLSSIRKLIRDGSIDLVINLPNNNTKFVHDNYVIRRTAVDSGIPLLTNFQVTKLFAEAVQKSRKVDSKSLFHYRQYSAGKAA

SEQ ID NO: 3676 - protein, 1053 aa, Artificial Sequence
  Description of Artificial Sequence: Synthetic polypeptide
MKRNYILGLDIGITSVGYGIIDYETRDVIDAGVRLFKEANVENNEGRRSKRGARRLKRRRRHRIQRVKKLLFDYNLLTDHSELSGINPYEARVKGLSQKLSEEEFSAALLHLAKRRGVHNVNEVEEDTGNELSTKEQISRNSKALEEKYVAELQLERLKKDGEVRGSINRFKTSDYVKEAKQLLKVQKAYHQLDQSFIDTYIDLLETRRTYYEGPGEGSPFGWKDIKEWYEMLMGHCTYFPEELRSVKYAYNADLYNALNDLNNLVITRDENEKLEYYEKFQIIENVFKQKKKPTLKQIAKEILVNEEDIKGYRVTSTGKPEFTNLKVYHDIKDITARKEIIENAELLDQIAKILTIYQSSEDIQEELTNLNSELTQEEIEQISNLKGYTGTHNLSLKAINLILDELWHTNDNQIAIFNRLKLVPKKVDLSQQKEIPTTLVDDFILSPVVKRSFIQSIKVINAIIKKYGLPNDIIIELAREKNSKDAQKMINEMQKRNRQTNERIEEIIRTTGKENAKYLIEKIKLHDMQEGKCLYSLEAIPLEDLLNNPFNYEVDHIIPRSVSFDNSFNNKVLVKQEENSKKGNRTPFQYLSSSDSKISYETFKKHILNLAKGKGRISKTKKEYLLEERDINRFSVQKDFINRNLVDTRYATRGLMNLLRSYFRVNNLDVKVKSINGGFTSFLRRKWKFKKERNKGYKHHAEDALIIANADFIFKEWKKLDKAKKVMENQMFEEKQAESMPEIETEQEYKEIFITPHQIKHIKDFKDYKYSHRVDKKPNRELINDTLYSTRKDDKGNTLIVNNLNGLYDKDNDKLKKLINKSPEKLLMYHHDPQTYQKLKLIMEQYGDEKNPLYKYYEETGNYLTKYSKKDNGPVIKKIKYYGNKLNAHLDITDDYPNSRNKVVKLSLKPYRFDVYLDNGVYKFVTVKNLDVIKKENYYEVNSKCYEEAKKLKKISNQAEFIASFYNNDLIKINGELYRVIGVNNDLLNRIEVNMIDITYREYLENMNDKRPPRIIKTIASKTQSIKKYSTDILGNLYEVKSKKHPQIIKKG

SEQ ID NO: 3677 - protein, 1353 aa, Artificial Sequence
  Description of Artificial Sequence: Synthetic polypeptide
AAGGILHLELLVAVGPDVFQAHQEDTERYVLTNLNIGAELLRDPSLGAQFRVHLVKMVILTEPEGAPNITANLTSSLLSVCGWSQTINPEDDTDPGHADLVLYITRFDLELPDGNRQVRGVTQLGGACSPTWSCLITEDTGFDLGVTIAHEIGHSFGLEHDGAPGSGCGPSGHVMASDGAAPRAGLAWSPCSRRQLLSLLSAGRARCVWDPPRPQPGSAGHPPDAQPGLYYSANEQCRVAFGPKAVACTFAREHLDMCQALSCHTDPLDQSSCSRLLVPLLDGTECGVEKWCSKGRCRSLVELTPIAAVHGRWSSWGPRSPCSRSCGGGVVTRRRQCNNPRPAFGGRACVGADLQAEMCNTQACEKTQLEFMSQQCARTDGQPLRSSPGGASFYHWGAAVPHSQGDALCRHMCRAIGESFIMKRGDSFLDGTRCMPSGPREDGTLSLCVSGSCRTFGCDGRMDSQQVWDRCQVCGGDNSTCSPRKGSFTAGRAREYVTFLTVTPNLTSVYIANHRPLFTHLAVRIGGRYVVAGKMSISPNTTYPSLLEDGRVEYRVALTEDRLPRLEEIRIWGPLQEDADIQVYRRYGEEYGNLTRPDITFTYFQPKPRQAWVWAAVRGPCSVSCGAGLRWVNYSCLDQARKELVETVQCQGSQQPPAWPEACVLEPCPPYWAVGDFGPCSASCGGGLRERPVRCVEAQGSLLKTLPPARCRAGAQQPAVALETCNPQPCPARWEVSEPSSCTSAGGAGLALENETCVPGADGLEAPVTEGPGSVDEKLPAPEPCVGMSCPPGWGHLDATSAGEKAPSPWGSIRTGAQAAHVWTPAAGSCSVSCGRGLMELRFLCMDSALRVPVQEELCGLASKPGSRREVCQAVPCPARWQYKLAACSVSCGRGVVRRILYCARAHGEDDGEEILLDTQCQGLPRPEPQEACSLEPCPPRWKVMSLGPCSASCGLGTARRSVACVQLDQGQDVEVDEAACAALVRPEASVPCLIADCTYRWHVGTWMECSVSCGDGIQRRRDTCLGPQAQAPVPADFCQHLPKPVTVRGCWAGPCVGQGTPSLVPHEEAAAPGRTTATPAGASLEWSQARGLLFSPAPQPRRLLPGPQENSVQSSACGRQHLEPTGTIDMRGPGQADCAVAIGRPLGEVVTLRVLESSLNCSAGDMLLLWGRLTWRKMCRKLLDMTFSSKTNTLVVRQRCGRPGGGVLLRYGSQLAPETFYRECDMQLFGPWGEIVSPSLSPATSNAGGCRLFINVAPHARIAIHALATNMGAGTEGANASYILIRDTHSLRTTAFHGQQVLYWESESSQAEMEFSEGFLKAQASLRGQYWTLQSWVPEMQDPQSWKGKEGT

SEQ ID NO: 3678 - protein, 431 aa, Artificial Sequence; identical to SEQ ID NO: 3579
  Description of Artificial Sequence: Synthetic polypeptide

SEQ ID NO: 3679 - protein, 160 aa, Artificial Sequence; identical to SEQ ID NO: 3563
  Description of Artificial Sequence: Synthetic polypeptide

SEQ ID NO: 3680 - protein, 133 aa, Artificial Sequence [sequence omitted]

SEQ ID NO: 3681 - protein, 54 aa, Artificial Sequence
  Description of Artificial Sequence: Synthetic polypeptide
MLQMAGQCSQNEYFDSLLHACIPCQLRCSSNTPPLTCQRYCNASVTNSVKGTNA

SEQ ID NO: 3682 - protein, 23 aa, Artificial Sequence
  Description of Artificial Sequence: Synthetic polypeptide
ILWTCLGLSLIISLAVFVLMFLL

SEQ ID NO: 3683 - protein, 107 aa, Artificial Sequence
  Description of Artificial Sequence: Synthetic polypeptide
RKINSEPLKDEFKNTGSGLLGMANIDLEKSRTGDEIILPRGLEYTVEECTCEDCIKSKPKVDSDHCFPLPAMEEGATILVTTKTNDYCKSLPAALSATEIEKSISAR

SEQ ID NO: 3684 - protein, 10 aa, Artificial Sequence
  Description of Artificial Sequence: Synthetic polypeptide
MLQMAGQCSQ

SEQ ID NO: 3685 - protein, 14 aa, Artificial Sequence
  Description of Artificial Sequence: Synthetic polypeptide
CSQNEYFDSLLHAC

SEQ ID NO: 3686 - protein, 13 aa, Artificial Sequence
  Description of Artificial Sequence: Synthetic polypeptide
NEYFDSLLHACIP

SEQ ID NO: 3687 - protein, 11 aa, Artificial Sequence
  Description of Artificial Sequence: Synthetic polypeptide
ACIPCQLRCSS

SEQ ID NO: 3688 - protein, 19 aa, Artificial Sequence
  Description of Artificial Sequence: Synthetic polypeptide
CQLRCSSNTPPLTCQRYCN

SEQ ID NO: 3689 - protein, 10 aa, Artificial Sequence
  Description of Artificial Sequence: Synthetic polypeptide
LTCQRYCNAS

SEQ ID NO: 3690 - protein, 488 aa, Artificial Sequence
  Description of Artificial Sequence: Synthetic polypeptide
MALPVTALLLPLALLLHAARPQVKLEESGGGLVQAGRSLRLSCAASEHTFSSHVMGWFRQAPGKERESVAVIGWRDISTSYADSVKGRFTISRDNAKKTLYLQMNSLKPEDTAVYYCAARRIDAADFDSWGQGTQVTVSSGGGGSEVQLVESGGGLVQAGGSLRLSCAASGRTFTMGWFRQAPGKEREFVAAISLSPTLAYYAESVKGRFTISRDNAKNTVVLQMNSLKPEDTALYYCAADRKSVMSIRPDYWGQGTQVTVSSTSTTTPAPRPPTPAPTIASQPLSLRPEACRPAAGGAVHTRGLDFACDIYIWAPLAGTCGVLLLSLVITLYCKRGRKKLLYIFKQPFMRPVQTTQEEDGCSCRFPEEEEGGCELRVKFSRSADAPAYQQGQNQLYNELNLGRREEYDVLDKRRGRDPEMGGKPRRKNPQEGLYNELQKDKMAEAYSEIGMKGERRRGKGHDGLYQGLSTATKDTYDALHMQALPPR

SEQ ID NO: 3691 - protein, 498 aa, Artificial Sequence
  Description of Artificial Sequence: Synthetic polypeptide
MALPVTALLLPLALLLHAARPQVKLEESGGGLVQAGRSLRLSCAASEHTFSSHVMGWFRQAPGKERESVAVIGWRDISTSYADSVKGRFTISRDNAKKTLYLQMNSLKPEDTAVYYCAARRIDAADFDSWGQGTQVTVSSGGGGSGGGGSGGGGSEVQLVESGGGLVQAGGSLRLSCAASGRTFTMGWFRQAPGKEREFVAAISLSPTLAYYAESVKGRFTISRDNAKNTVVLQMNSLKPEDTALYYCAADRKSVMSIRPDYWGQGTQVTVSSTSTTTPAPRPPTPAPTIASQPLSLRPEACRPAAGGAVHTRGLDFACDIYIWAPLAGTCGVLLLSLVITLYCKRGRKKLLYIFKQPFMRPVQTTQEEDGCSCRFPEEEEGGCELRVKFSRSADAPAYQQGQNQLYNELNLGRREEYDVLDKRRGRDPEMGGKPRRKNPQEGLYNELQKDKMAEAYSEIGMKGERRRGKGHDGLYQGLSTATKDTYDALHMQALPPR

SEQ ID NO: 3692 - protein, 508 aa, Artificial Sequence
  Description of Artificial Sequence: Synthetic polypeptide
MALPVTALLLPLALLLHAARPQVKLEESGGGLVQAGRSLRLSCAASEHTFSSHVMGWFRQAPGKERESVAVIGWRDISTSYADSVKGRFTISRDNAKKTLYLQMNSLKPEDTAVYYCAARRIDAADFDSWGQGTQVTVSSGGGGSGGGGSGGGGSGGGGSGGGGSEVQLVESGGGLVQAGGSLRLSCAASGRTFTMGWFRQAPGKEREFVAAISLSPTLAYYAESVKGRFTISRDNAKNTVVLQMNSLKPEDTALYYCAADRKSVMSIRPDYWGQGTQVTVSSTSTTTPAPRPPTPAPTIASQPLSLRPEACRPAAGGAVHTRGLDFACDIYIWAPLAGTCGVLLLSLVITLYCKRGRKKLLYIFKQPFMRPVQTTQEEDGCSCRFPEEEEGGCELRVKFSRSADAPAYQQGQNQLYNELNLGRREEYDVLDKRRGRDPEMGGKPRRKNPQEGLYNELQKDKMAEAYSEIGMKGERRRGKGHDGLYQGLSTATKDTYDALHMQALPPR

SEQ ID NO: 3693 - protein, 493 aa, Artificial Sequence
  Description of Artificial Sequence: Synthetic polypeptide
MALPVTALLLPLALLLHAARPEVQLVESGGGLVQAGGSLRLSCAASGRTFTMGWFRQAPGKEREFVAAISLSPTLAYYAESVKGRFTISRDNAKNTVVLQMNSLKPEDTALYYCAADRKSVMSIRPDYWGQGTQVTVSSGGGGSGGGGSQVKLEESGGGLVQAGRSLRLSCAASEHTFSSHVMGWFRQAPGKERESVAVIGWRDISTSYADSVKGRFTISRDNAKKTLYLQMNSLKPEDTAVYYCAARRIDAADFDSWGQGTQVTVSSTSTTTPAPRPPTPAPTIASQPLSLRPEACRPAAGGAVHTRGLDFACDIYIWAPLAGTCGVLLLSLVITLYCKRGRKKLLYIFKQPFMRPVQTTQEEDGCSCRFPEEEEGGCELRVKFSRSADAPAYQQGQNQLYNELNLGRREEYDVLDKRRGRDPEMGGKPRRKNPQEGLYNELQKDKMAEAYSEIGMKGERRRGKGHDGLYQGLSTATKDTYDALHMQALPPR

SEQ ID NO: 3694 - protein, 498 aa, Artificial Sequence
  Description of Artificial Sequence: Synthetic polypeptide
MALPVTALLLPLALLLHAARPEVQLVESGGGLVQAGGSLRLSCAASGRTFTMGWFRQAPGKEREFVAAISLSPTLAYYAESVKGRFTISRDNAKNTVVLQMNSLKPEDTALYYCAADRKSVMSIRPDYWGQGTQVTVSSGGGGSGGGGSGGGGSQVKLEESGGGLVQAGRSLRLSCAASEHTFSSHVMGWFRQAPGKERESVAVIGWRDISTSYADSVKGRFTISRDNAKKTLYLQMNSLKPEDTAVYYCAARRIDAADFDSWGQGTQVTVSSTSTTTPAPRPPTPAPTIASQPLSLRPEACRPAAGGAVHTRGLDFACDIYIWAPLAGTCGVLLLSLVITLYCKRGRKKLLYIFKQPFMRPVQTTQEEDGCSCRFPEEEEGGCELRVKFSRSADAPAYQQGQNQLYNELNLGRREEYDVLDKRRGRDPEMGGKPRRKNPQEGLYNELQKDKMAEAYSEIGMKGERRRGKGHDGLYQGLSTATKDTYDALHMQALPPR

SEQ ID NO: 3695 - protein, 503 aa, Artificial Sequence
  Description of Artificial Sequence: Synthetic polypeptide
MALPVTALLLPLALLLHAARPEVQLVESGGGLVQAGGSLRLSCAASGRTFTMGWFRQAPGKEREFVAAISLSPTLAYYAESVKGRFTISRDNAKNTVVLQMNSLKPEDTALYYCAADRKSVMSIRPDYWGQGTQVTVSSGGGGSGGGGSGGGGSGGGGSQVKLEESGGGLVQAGRSLRLSCAASEHTFSSHVMGWFRQAPGKERESVAVIGWRDISTSYADSVKGRFTISRDNAKKTLYLQMNSLKPEDTAVYYCAARRIDAADFDSWGQGTQVTVSSTSTTTPAPRPPTPAPTIASQPLSLRPEACRPAAGGAVHTRGLDFACDIYIWAPLAGTCGVLLLSLVITLYCKRGRKKLLYIFKQPFMRPVQTTQEEDGCSCRFPEEEEGGCELRVKFSRSADAPAYQQGQNQLYNELNLGRREEYDVLDKRRGRDPEMGGKPRRKNPQEGLYNELQKDKMAEAYSEIGMKGERRRGKGHDGLYQGLSTATKDTYDALHMQALPPR

SEQ ID NO: 3696 - protein, 122 aa, Artificial Sequence
  Description of Artificial Sequence: Synthetic polypeptide
QVQLVESGGGLVQPGGSLRLSCEASGFTLDYYAIGWFRQAPGKEREGVICISRSDGSTYYADSVKGRFTISRDNAKKTVYLQMISLKPEDTAAYYCAAGADCSGYLRDYEFRGQGTQVTVSS

SEQ ID NO: 3697 - protein, 128 aa, Artificial Sequence
  Description of Artificial Sequence: Synthetic polypeptide
QVKLEESGGRLVQPRGSLRLSCAGSGRTFSTYGMAWFRQAPGKEREFVASKASMNYSGRTYYADSVKGRFTIARDNAKNMVFLQMNNLKPEDTAVYYCAAGTGCSTYGCFDAQIIDYWGKGTLVTVSS

SEQ ID NO: 3698 - protein, 118 aa, Artificial Sequence
  Description of Artificial Sequence: Synthetic polypeptide
EVQLVESGGGLVQAGGSLRLSCAASGRTFTMGWFRQAPGKEREFVAAISLSPTLAYYAESVKGRFTISRDNAKNTVVLQMNSLKPEDTALYYCAADRKSVMSIRPDYWGQGTQVTVSS

SEQ ID NO: 3699 - protein, 120 aa, Artificial Sequence
  Description of Artificial Sequence: Synthetic polypeptide
AVQLVDSGGGLVQPGGSLRLSCVASGGIFVINAMGWYRQAPGKQRELVASIRGLGRTNYDDSVKGRFTISRDNANNTVYLQMNSLEPEDTAVYYCTVYVTLLGGVNRDYWGQGTQVTVSS

SEQ ID NO: 3700 - protein, 119 aa, Artificial Sequence
  Description of Artificial Sequence: Synthetic polypeptide
EVQLVESGGGLVQAGGSLRLSCAASGRTFSSIVMGWFRQAPGKEREFVGAIMWNDGITYLQDSVKGRFTIFRDNAKNTVYLQMNSLKLEDTAVYYCAASKGRYSEYEYWGQGTQVTVSS

SEQ ID NO: 3701 - protein, 128 aa, Artificial Sequence
  Description of Artificial Sequence: Synthetic polypeptide
EVQLVESGGGVVQAGGSLTVSCTASGFTFDRAVIVWFRQAPGKGREGVSFIKPSDGTIYYIDSLKGRFTISSDIAKNTVYLQMKSLESEDSAVYYCAASPEDWYTDWIDWSIYRWQHWGQGTQVTVSS

SEQ ID NO: 3702 - protein, 119 aa, Artificial Sequence
  Description of Artificial Sequence: Synthetic polypeptide
EVQLVESGGGMVQAGDSLRLSCVQSTYTVNSDVMGWFRQAPGKEREFVGAIMWNDGITYLQDSVKGRFTIFRDNAKNTVYLQMNSLKLEDTAVYYCAASKGRYSEYEYWGQGTQVTVSS

SEQ ID NO: 3703 - protein, 120 aa, Artificial Sequence
  Description of Artificial Sequence: Synthetic polypeptide
AVQLVESGGGLVQAGDSLRLSCTASGATLTNDHMAWFRQAPGKGREFVAAIDWSGRTTNYADPVEGRFTISRNNAKNTVYLEMNSLKLEDTAVYYCAVLRAWISYDNDYWGQGTQVTVSS

SEQ ID NO: 3704 - protein, 120 aa, Artificial Sequence
  Description of Artificial Sequence: Synthetic polypeptide
QVQLVESGGGLVQAGGSLRLSCAASGGTLSKNTVAWFRQAPGKERGFVASITWDGRTTYYADSVKGRFTISRDNAKNTVYLQMNSLKPEDTAVYVCADLGKWPAGPADYWGQGTQVTVSS

SEQ ID NO: 3705 - protein, 119 aa, Artificial Sequence
  Description of Artificial Sequence: Synthetic polypeptide
QVKLEESGGGLVQAGRSLRLSCAASEHTFSSHVMGWFRQAPGKERESVAVIGWRDISTSYADSVKGRFTISRDNAKKTLYLQMNSLKPEDTAVYYCAARRIDAADFDSWGQGTQVTVSS

SEQ ID NO: 3706 - protein, 119 aa, Artificial Sequence
  Description of Artificial Sequence: Synthetic polypeptide
AVQLVESGGGLVQAGDSLRLTCTASGRAFSTYFMAWFRQAPGKEREFVAGIAWSGGSTAYADSVKGRFTISRDNAKNTVYLQMNSLKSEDTAVYYCASRGIEVEEFGAWGQGTQVTVSS

SEQ ID NO: 3707 - protein, 122 aa, Artificial Sequence; identical to SEQ ID NO: 3696
  Description of Artificial Sequence: Synthetic polypeptide

SEQ ID NO: 3708 - protein, 119 aa, Artificial Sequence; identical to SEQ ID NO: 3705
  Description of Artificial Sequence: Synthetic polypeptide

SEQ ID NO: 3709 - protein, 118 aa, Artificial Sequence; identical to SEQ ID NO: 3698
  Description of Artificial Sequence: Synthetic polypeptide

SEQ ID NO: 3710 - protein, 124 aa, Artificial Sequence
  Description of Artificial Sequence: Synthetic polypeptide
EVQLVESGGGLVPPGGSLRLSCTASGSTVSINVMAWYRQVSGKQRELVAAVTRDGRKSCGDSVKGRFTISRDGAKNAVYLQMNSLKPEDTAVYLCGADGWGATTLDYTYGMDYWGKGTQVTVSS

SEQ ID NO: 3711 - protein, 118 aa, Artificial Sequence
  Description of Artificial Sequence: Synthetic polypeptide
AVQLVESGGGLVQAGGSLRLSCAASGRTFTMGWFRQAPGKERGFVASITWDGRSAYYAESVKGRFTISRDNAKNTVVLQMNSLKPEDTALYYCAADRKSVMSIRPDYWGQGTQVTVSS

SEQ ID NO: 3712 - protein, 122 aa, Artificial Sequence
  Description of Artificial Sequence: Synthetic polypeptide
QVQLVESGGGLVQPGGSLRLACEAPGSGNSINAMGWYRQTPGKRRELVATITRGGSTNYGPSVKGRFTITRDNVKNTVHLQMNSLKPDDTAVYYCNAERLDGSGYGYEYDYWGQGTQVTVSS

SEQ ID NO: 3713 - protein, 121 aa, Artificial Sequence
  Description of Artificial Sequence: Synthetic polypeptide
QVKLEESGGGLVQAGGSLRLSCAASGGTLSKNTVAWVRQAPGKERGFVTSITCDGRTTYYANSVNGRFPINRNNAENLVVLQMNSLKPDDTALYYCAAYRKSIMSIQPDYWGQGTQVTVSS

SEQ ID NO: 3714 - protein, 121 aa, Artificial Sequence
  Description of Artificial Sequence: Synthetic polypeptide
DVQLVESGGGLVQAGGSLRLSCAASGRTFSSIVMGWFRQAPGKEREFVGAIMWNDGLTYLQGSVKGRFTISRDNAKNTVVLQMNSLKPEDTALYYCAADRKSVMSIRPDYWGQGTQVTVSS

SEQ ID NO: 3715 - protein, 116 aa, Artificial Sequence
  Description of Artificial Sequence: Synthetic polypeptide
QVQLVESGGGLVQAGGSLRLSCAASGRTFTMGWFRQAPGKEREFVAAISLSPTLAYYAESVKGRFTISRDNAKNTVVLQMNSLKPEDTAVYYCAARRIDAADFDSWGQGTQVTVSS

SEQ ID NO: 3716 - protein, 120 aa, Artificial Sequence; identical to SEQ ID NO: 3704
  Description of Artificial Sequence: Synthetic polypeptide

SEQ ID NO: 3717 - protein, 121 aa, Artificial Sequence
  Description of Artificial Sequence: Synthetic polypeptide
QVQLVESGGGLVQPGGSLTLSCAASGSIDSINTMDWFRQAPGKEREFVAAISLSPTLAYYAESVKGRFTISRDNAKNTVVLQMNSLKPEDTALYYCAADRKSVMSIRPDYWGQGTQVTVSS

SEQ ID NO: 3718 - protein, 120 aa, Artificial Sequence
  Description of Artificial Sequence: Synthetic polypeptide
DVQLVESGGGLVQAGGSLRLSCAASGGTLSKNTVAWVRQAPGKERGFVTSITCDGRTTYYANSVKGRFPISRDNAENTVYLQMNSLKPEDTAGYVCADLGKWPAGSADYWGQGTHVTVSS

SEQ ID NO: 3719 - protein, 121 aa, Artificial Sequence
  Description of Artificial Sequence: Synthetic polypeptide
QVKLEESGGGLVQPGGSLRLSCTASEFTFSDYWMHWVRQAPGKGLEWVASIDTSGQTTYYADSLKGRFTISRDNAKSTLYLQMNSLKSEDTGVYFCAKRYRGGTWYGMANWGKGTQVTVSS

SEQ ID NO: 3720 - protein, 120 aa, Artificial Sequence
  Description of Artificial Sequence: Synthetic polypeptide
QVQLVESGGGLVQAGGSLRLSCAASGRTLSSNTMAWFRQAPGKEREFVASTTWNGRSTYYADSVKGRFTISRDNAKNTMYLQMNSLKPEDTAVYVCADLGKWPAGPADYWGQGTQVTVSS

SEQ ID NO: 3721 - protein, 116 aa, Artificial Sequence
  Description of Artificial Sequence: Synthetic polypeptide
QVQLVESGGGLVQAGGSLRLSCAASGRTFTMGWFRQAPGKQRELVADISGGRTNYADSVKGRFTISRDNAKNTVYLQMNSLKPEDTAVYYCAADRKSVMSIRPDYWGQGTQVTVSS

SEQ ID NO: 3722 - protein, 104 aa, Artificial Sequence
  Description of Artificial Sequence: Synthetic polypeptide
QVQLVESGGGLVQAGASLRLSCAASGRTFTVAAISLSPTLAYYAESVKGRFTISRDNAKNTVVLQMNSLKPEDTALYYCAADRKSVMSIRPDYWGQGTQVTVSS

SEQ ID NO: 3723 - protein, 125 aa, Artificial Sequence
  Description of Artificial Sequence: Synthetic polypeptide
DVQLVESGGGLEQAGGSLRLSCAASGGTLSKNTVAWFRQAPGKERGFVASITWDGRTTYYADSVKGRFTISRDNAKNTVYLQMNSLKPEDTAVYYCASTASCHLFGLGSGAFVSWGRGTQVTVSS

SEQ ID NO: 3724 - protein, 116 aa, Artificial Sequence
  Description of Artificial Sequence: Synthetic polypeptide
AVQLVESGGGLVQAGGSLRLSCAASGRTFTMGWFHQAPGKEREFVAAISLSPTLAYYAESVKGRFTISRDNAKNTVVLQMNSLKPEDTALYYCAASKDRYSEYEYWGQGTQVTVSS

SEQ ID NO: 3725 - protein, 114 aa, Artificial Sequence
  Description of Artificial Sequence: Synthetic polypeptide
QVKLEESGGGLVQAGGSLRLSCAASGRTFTMGWFRQAPGKEREFVAAISLSPTLAYYAESVKGRFTISRDNAKNTVVLQMNSLKPEDTALYYCAKKNGGPVDYWGKGTQVTVSS

SEQ ID NO: 3726 - protein, 119 aa, Artificial Sequence
  Description of Artificial Sequence: Synthetic polypeptide
DVQLVESGGGLVQPGGSLRLSCAASGRTFSSIVMGWFRQAPGKEREFVGAIMWNDGITYLQDSVKGRFTIFRDNAKNTVYLQMNSLKLEDTAVYYCAASKGRYSEYEYWGQGTQVTVSS

SEQ ID NO: 3727 - protein, 118 aa, Artificial Sequence
  Description of Artificial Sequence: Synthetic polypeptide
QVKLEESGGRLVQAGGSLKLSWAASGRTFTMGWFRQAPGKEREFVTAINLSPTLTYYAESVKGRFPISRNNAQNTVVLQMNSLKPEDTALYYCAAERKSVMAIPPDYWGQGTQVTVSS

SEQ ID NO: 3728 - protein, 118 aa, Artificial Sequence; identical to SEQ ID NO: 3727
  Description of Artificial Sequence: Synthetic polypeptide

SEQ ID NO: 3729 - protein, 118 aa, Artificial Sequence
  Description of Artificial Sequence: Synthetic polypeptide
EVQLVESGGGLVQAGGSLRLSCAASGRTFTMGGFRRVPRDEREFVASITLIPTFPYYAYSVKGRFALFRDNPNNTVILLMISLKPEDPDLYYCASYRKYLMSILPDYWGQGTQGTVSS

SEQ ID NO: 3730 - protein, 124 aa, Artificial Sequence
  Description of Artificial Sequence: Synthetic polypeptide
QVKLEESGGGLVQAGGSLRLSCAASGRTFTMGWFRQAPGKEREFVAAISLSPTLAYYAESVKGRFTISRDNAKNTVDLQMNSLKPEDTAVYFCAANRNSQRVIAALSWIGMNYWGEWTQVTVSS

SEQ ID NO: 3731 - protein, 116 aa, Artificial Sequence
  Description of Artificial Sequence: Synthetic polypeptide
QVQLVESGGGLVQAGGSLRLSCAASGRTFTMGWFRQAPGKEREFVAAISLSPTLAYYAESVKGRFTISRDNAKKTLYLRMNSLKPEDTAVYYCAARRIDAADFDSWGQGTQVTVSS

SEQ ID NO: 3732 - protein, 116 aa, Artificial Sequence
  Description of Artificial Sequence: Synthetic polypeptide
QVKLEESGGGLVQAGGSLRLSCAASGRTFTMGWFRRAPGKERESVAVIGWRDINASYADSVKGRFAISRDNAKKTLYLQMNSLKPEDTAVYYCAARRIDATDFDSWGQGTQVTVSS

SEQ ID NO: 3733 - protein, 119 aa, Artificial Sequence
  Description of Artificial Sequence: Synthetic polypeptide
QVKLEESGGGLVQTGGSLRLSCAASEHTFSNHVMGWFRQAPGKERESVAVIGWRDISTSYADSVKGRFTISRDNAKKTLYLQMNSLKPEDTAVYYCAARRIDAADFDSRGQGTQVTVSS

SEQ ID NO: 3734 - protein, 123 aa, Artificial Sequence
  Description of Artificial Sequence: Synthetic polypeptide
AVQLVDSGGGLVQAGGSLRISCAVSGRTSSNYILAWFRQAPGKERDFVAHISRSGGKSGYGDSVKGRFTISRDNAENTVRVYLQMNSLKPGDTAVYYCNRPLWYGSPTLIDYWGQGTQVTVSS

SEQ ID NO: 3735 - protein, 118 aa, Artificial Sequence
  Description of Artificial Sequence: Synthetic polypeptide
QVQLVESGGGLVQAGGSLRLSCAASGRTFTMGWFRQAPGKEREFVAAISLSPTLAYYAESVKGRFTISRDNAKNTVVLQMNSLKPEDTALYYCAADRKSVMSIRPDYWGQGTQVTVSS

SEQ ID NO: 3736 - protein, 118 aa, Artificial Sequence
  Description of Artificial Sequence: Synthetic polypeptide
AVQLVDSGGGLVQAGGSLRLSCAASGRTFTMGWFRQAPGKEREFVAAISLSPTLAYYAEPVKGRFTISRDNAKNTVVLQMNSLKPEDTALYYCAADRKSVMSIRPDYWGQGTQVTVSS

SEQ ID NO: 3737 - protein, 121 aa, Artificial Sequence
  Description of Artificial Sequence: Synthetic polypeptide
DVQLVESGGGSVQTGGSLRLSCTASGRTLNNFVMGWFRQAPGKEREFVAAISLSPTLAYYVESVKGRFTISRDNAKNTVVLQMNSLKPEDTALYYCAADRKSVMSIRPDYWGQGTQVTVSS

SEQ ID NO: 3738 - protein, 210 aa, Artificial Sequence
  Description of Artificial Sequence: Synthetic polypeptide
APGKEREGVICISRSDGSTYYADSVKGRFTISRDNAKKTVYLQMISLKPEDTAAYYCAAGADCSGYLRDYEFRGQGTQVTVSSGGGGSQVQLVESGGGLVQPGGSLRLSCEASGFTLDYYAIGWFRQAPGKEREGVICISRSDGSTYYADSVKGRFTISRDNAKKTVYLQMISLKPEDTAAYYCAAGADCSGYLRDYEFRGQGTQVTVSS

SEQ ID NO: 3739 - protein, 376 aa, Artificial Sequence
  Description of Artificial Sequence: Synthetic polypeptide
QVQLVESGGGLVQPGGSLRLSCEASGFTLDYYAIGWFRQAPGKEREGVICISRSDGSTYYADSVKGRFTISRDNAKKTVYLQMISLKPEDTAAYYCAAGADCSGYLRDYEFRGQGTQVTVSSGGGGSQVQLVESGGGLVQPGGSLRLSCEASGFTLDYYAIGWFRQAPGKEREGVICISRSDGSTYYADSVKGRFTISRDNAKKTVYLQMISLKPEDTAAYYCAAGADCSGYLRDYEFRGQGTQVTVSSGGGGSQVQLVESGGGLVQPGGSLRLSCEASGFTLDYYAIGWFRQAPGKEREGVICISRSDGSTYYADSVKGRFTISRDNAKKTVYLQMISLKPEDTAAYYCAAGADCSGYLRDYEFRGQGTQVTVSS

SEQ ID NO: 3740 - protein, 242 aa, Artificial Sequence
  Description of Artificial Sequence: Synthetic polypeptide
QVKLEESGGGLVQAGRSLRLSCAASEHTFSSHVMGWFRQAPGKERESVAVIGWRDISTSYADSVKGRFTISRDNAKKTLYLQMNSLKPEDTAVYYCAARRIDAADFDSWGQGTQVTVSSGGGGSEVQLVESGGGLVQAGGSLRLSCAASGRTFTMGWFRQAPGKEREFVAAISLSPTLAYYAESVKGRFTISRDNAKNTVVLQMNSLKPEDTALYYCAADRKSVMSIRPDYWGQGTQVTVSS

SEQ ID NO: 3741 - protein, 252 aa, Artificial Sequence
  Description of Artificial Sequence: Synthetic polypeptide
QVKLEESGGGLVQAGRSLRLSCAASEHTFSSHVMGWFRQAPGKERESVAVIGWRDISTSYADSVKGRFTISRDNAKKTLYLQMNSLKPEDTAVYYCAARRIDAADFDSWGQGTQVTVSSGGGGSGGGGSGGGGSEVQLVESGGGLVQAGGSLRLSCAASGRTFTMGWFRQAPGKEREFVAAISLSPTLAYYAESVKGRFTISRDNAKNTVVLQMNSLKPEDTALYYCAADRKSVMSIRPDYWGQGTQVTVSS

SEQ ID NO: 3742 - protein, 262 aa, Artificial Sequence
  Description of Artificial Sequence: Synthetic polypeptide
QVKLEESGGGLVQAGRSLRLSCAASEHTFSSHVMGWFRQAPGKERESVAVIGWRDISTSYADSVKGRFTISRDNAKKTLYLQMNSLKPEDTAVYYCAARRIDAADFDSWGQGTQVTVSSGGGGSGGGGSGGGGSGGGGSGGGGSEVQLVESGGGLVQAGGSLRLSCAASGRTFTMGWFRQAPGKEREFVAAISLSPTLAYYAESVKGRFTISRDNAKNTVVLQMNSLKPEDTALYYCAADRKSVMSIRPDYWGQGTQVTVSS

SEQ ID NO: 3743 - protein, 247 aa, Artificial Sequence
  Description of Artificial Sequence: Synthetic polypeptide
EVQLVESGGGLVQAGGSLRLSCAASGRTFTMGWFRQAPGKEREFVAAISLSPTLAYYAESVKGRFTISRDNAKNTVVLQMNSLKPEDTALYYCAADRKSVMSIRPDYWGQGTQVTVSSGGGGSGGGGSQVKLEESGGGLVQAGRSLRLSCAASEHTFSSHVMGWFRQAPGKERESVAVIGWRDISTSYADSVKGRFTISRDNAKKTLYLQMNSLKPEDTAVYYCAARRIDAADFDSWGQGTQVTVSS

SEQ ID NO: 3744 - protein, 252 aa, Artificial Sequence
  Description of Artificial Sequence: Synthetic polypeptide
EVQLVESGGGLVQAGGSLRLSCAASGRTFTMGWFRQAPGKEREFVAAISLSPTLAYYAESVKGRFTISRDNAKNTVVLQMNSLKPEDTALYYCAADRKSVMSIRPDYWGQGTQVTVSSGGGGSGGGGSGGGGSQVKLEESGGGLVQAGRSLRLSCAASEHTFSSHVMGWFRQAPGKERESVAVIGWRDISTSYADSVKGRFTISRDNAKKTLYLQMNSLKPEDTAVYYCAARRIDAADFDSWGQGTQVTVSS

SEQ ID NO: 3745 - protein, 257 aa, Artificial Sequence
  Description of Artificial Sequence: Synthetic polypeptide
EVQLVESGGGLVQAGGSLRLSCAASGRTFTMGWFRQAPGKEREFVAAISLSPTLAYYAESVKGRFTISRDNAKNTVVLQMNSLKPEDTALYYCAADRKSVMSIRPDYWGQGTQVTVSSGGGGSGGGGSGGGGSGGGGSQVKLEESGGGLVQAGRSLRLSCAASEHTFSSHVMGWFRQAPGKERESVAVIGWRDISTSYADSVKGRFTISRDNAKKTLYLQMNSLKPEDTAVYYCAARRIDAADFDSWGQGTQVTVSS

SEQ ID NO: 3746 - protein, 243 aa, Artificial Sequence
  Description of Artificial Sequence: Synthetic polypeptide
QVKLEESGGGLVQAGRSLRLSCAASEHTFSSHVMGWFRQAPGKERESVAVIGWRDISTSYADSVKGRFTISRDNAKKTLYLQMNSLKPEDTAVYYCAARRIDAADFDSWGQGTQVTVSSGGGGSAVQLVESGGGLVQAGDSLRLTCTASGRAFSTYFMAWFRQAPGKEREFVAGIAWSGGSTAYADSVKGRFTISRDNAKNTVYLQMNSLKSEDTAVYYCASRGIEVEEFGAWGQGTQVTVSS

SEQ ID NO: 3747 - protein, 253 aa, Artificial Sequence
  Description of Artificial Sequence: Synthetic polypeptide
QVKLEESGGGLVQAGRSLRLSCAASEHTFSSHVMGWFRQAPGKERESVAVIGWRDISTSYADSVKGRFTISRDNAKKTLYLQMNSLKPEDTAVYYCAARRIDAADFDSWGQGTQVTVSSGGGGSGGGGSGGGGSAVQLVESGGGLVQAGDSLRLTCTASGRAFSTYFMAWFRQAPGKEREFVAGIAWSGGSTAYADSVKGRFTISRDNAKNTVYLQMNSLKSEDTAVYYCASRGIEVEEFGAWGQGTQVTVSS

SEQ ID NO: 3748 - protein, 263 aa, Artificial Sequence
  Description of Artificial Sequence: Synthetic polypeptide
QVKLEESGGGLVQAGRSLRLSCAASEHTFSSHVMGWFRQAPGKERESVAVIGWRDISTSYADSVKGRFTISRDNAKKTLYLQMNSLKPEDTAVYYCAARRIDAADFDSWGQGTQVTVSSGGGGSGGGGSGGGGSGGGGSGGGGSAVQLVESGGGLVQAGDSLRLTCTASGRAFSTYFMAWFRQAPGKEREFVAGIAWSGGSTAYADSVKGRFTISRDNAKNTVYLQMNSLKSEDTAVYYCASRGIEVEEFGAWGQGTQVTVSS

SEQ ID NO: 3749 - protein, 248 aa, Artificial Sequence
  Description of Artificial Sequence: Synthetic polypeptide
AVQLVESGGGLVQAGDSLRLTCTASGRAFSTYFMAWFRQAPGKEREFVAGIAWSGGSTAYADSVKGRFTISRDNAKNTVYLQMNSLKSEDTAVYYCASRGIEVEEFGAWGQGTQVTVSSGGGGSGGGGSQVKLEESGGGLVQAGRSLRLSCAASEHTFSSHVMGWFRQAPGKERESVAVIGWRDISTSYADSVKGRFTISRDNAKKTLYLQMNSLKPEDTAVYYCAARRIDAADFDSWGQGTQVTVSS

SEQ ID NO: 3750 - protein, 253 aa, Artificial Sequence
  Description of Artificial Sequence: Synthetic polypeptide
AVQLVESGGGLVQAGDSLRLTCTASGRAFSTYFMAWFRQAPGKEREFVAGIAWSGGSTAYADSVKGRFTISRDNAKNTVYLQMNSLKSEDTAVYYCASRGIEVEEFGAWGQGTQVTVSSGGGGSGGGGSGGGGSQVKLEESGGGLVQAGRSLRLSCAASEHTFSSHVMGWFRQAPGKERESVAVIGWRDISTSYADSVKGRFTISRDNAKKTLYLQMNSLKPEDTAVYYCAARRIDAADFDSWGQGTQVTVSS

SEQ ID NO: 3751 - protein, 219 aa, Artificial Sequence
  Description of Artificial Sequence: Synthetic polypeptide
APGKEREFVAGIAWSGGSTAYADSVKGRFTISRDNAKNTVYLQMNSLKSEDTAVYYCASRGIEVEEFGAWGQGTQVTVSSGGGGSGGGGSGGGGSGGGGSQVKLEESGGGLVQAGRSLRLSCAASEHTFSSHVMGWFRQAPGKERESVAVIGWRDISTSYADSVKGRFTISRDNAKKTLYLQMNSLKPEDTAVYYCAARRIDAADFDSWGQGTQVTVSS

SEQ ID NO: 3752 - protein, 252 aa, Artificial Sequence
  Description of Artificial Sequence: Synthetic polypeptide
EVQLVESGGGMVQAGDSLRLSCVQSTYTVNSDVMGWFRQAPGKEREFVGAIMWNDGITYLQDSVKGRFTIFRDNAKNTVYLQMNSLKLEDTAVYYCAASKGRYSEYEYWGQGTQVTVSSGGGGSQVKLEESGGRLVQPRGSLRLSCAGSGRTFSTYGMAWFRQAPGKEREFVASKASMNYSGRTYYADSVKGRFTIARDNAKNMVFLQMNNLKPEDTAVYYCAAGTGCSTYGCFDAQIIDYWGKGTLVTVSS

SEQ ID NO: 3753 - protein, 262 aa, Artificial Sequence
  Description of Artificial Sequence: Synthetic polypeptide
EVQLVESGGGMVQAGDSLRLSCVQSTYTVNSDVMGWFRQAPGKEREFVGAIMWNDGITYLQDSVKGRFTIFRDNAKNTVYLQMNSLKLEDTAVYYCAASKGRYSEYEYWGQGTQVTVSSGGGGSGGGGSGGGGSQVKLEESGGRLVQPRGSLRLSCAGSGRTFSTYGMAWFRQAPGKEREFVASKASMNYSGRTYYADSVKGRFTIARDNAKNMVFLQMNNLKPEDTAVYYCAAGTGCSTYGCFDAQIIDYWGKGTLVTVSS

SEQ ID NO: 3754 - protein, 272 aa, Artificial Sequence
  Description of Artificial Sequence: Synthetic polypeptide
EVQLVESGGGMVQAGDSLRLSCVQSTYTVNSDVMGWFRQAPGKEREFVGAIMWNDGITYLQDSVKGRFTIFRDNAKNTVYLQMNSLKLEDTAVYYCAASKGRYSEYEYWGQGTQVTVSSGGGGSGGGGSGGGGSGGGGSGGGGSQVKLEESGGRLVQPRGSLRLSCAGSGRTFSTYGMAWFRQAPGKEREFVASKASMNYSGRTYYADSVKGRFTIARDNAKNMVFLQMNNLKPEDTAVYYCAAGTGCSTYGCFDAQIIDYWGKGTLVTVSS

SEQ ID NO: 3755 - protein, 257 aa, Artificial Sequence
  Description of Artificial Sequence: Synthetic polypeptide
EVQLVESGGGMVQAGDSLRLSCVQSTYTVNSDVMGWFRQAPGKEREFVGAIMWNDGITYLQDSVKGRFTIFRDNAKNTVYLQMNSLKLEDTAVYYCAASKGRYSEYEYWGQGTQVTVSSGGGGSGGGGSQVKLEESGGRLVQPRGSLRLSCAGSGRTFSTYGMAWFRQAPGKEREFVASKASMNYSGRTYYADSVKGRFTIARDNAKNMVFLQMNNLKPEDTAVYYCAAGTGCSTYGCFDAQIIDYWGKGTLVTVSS

SEQ ID NO: 3756 - protein, 262 aa, Artificial Sequence; identical to SEQ ID NO: 3753
  Description of Artificial Sequence: Synthetic polypeptide

SEQ ID NO: 3757 - protein, 267 aa, Artificial Sequence
  Description of Artificial Sequence: Synthetic polypeptide
EVQLVESGGGMVQAGDSLRLSCVQSTYTVNSDVMGWFRQAPGKEREFVGAIMWNDGITYLQDSVKGRFTIFRDNAKNTVYLQMNSLKLEDTAVYYCAASKGRYSEYEYWGQGTQVTVSSGGGGSGGGGSGGGGSGGGGSQVKLEESGGRLVQPRGSLRLSCAGSGRTFSTYGMAWFRQAPGKEREFVASKASMNYSGRTYYADSVKGRFTIARDNAKNMVFLQMNNLKPEDTAVYYCAAGTGCSTYGCFDAQIIDYWGKGTLVTVSS

SEQ ID NO: 3758 - protein, 254 aa, Artificial Sequence
  Description of Artificial Sequence: Synthetic polypeptide
QVKLEESGGRLVQPRGSLRLSCAGSGRTFSTYGMAWFRQAPGKEREFVASKASMNYSGRTYYADSVKGRFTIARDNAKNMVFLQMNNLKPEDTAVYYCAAGTGCSTYGCFDAQIIDYWGKGTLVTVSSGGGGSQVKLEESGGGLVQAGGSLRLSCAASGGTLSKNTVAWVRQAPGKERGFVTSITCDGRTTYYANSVNGRFPINRNNAENLVVLQMNSLKPDDTALYYCAAYRKSIMSIQPDYWGQGTQVTVSS

SEQ ID NO: 3759 - protein, 264 aa, Artificial Sequence
  Description of Artificial Sequence: Synthetic polypeptide
QVKLEESGGRLVQPRGSLRLSCAGSGRTFSTYGMAWFRQAPGKEREFVASKASMNYSGRTYYADSVKGRFTIARDNAKNMVFLQMNNLKPEDTAVYYCAAGTGCSTYGCFDAQIIDYWGKGTLVTVSSGGGGSGGGGSGGGGSQVKLEESGGGLVQAGGSLRLSCAASGGTLSKNTVAWVRQAPGKERGFVTSITCDGRTTYYANSVNGRFPINRNNAENLVVLQMNSLKPDDTALYYCAAYRKSIMSIQPDYWGQGTQVTVSS

SEQ ID NO: 3760 - protein, 274 aa, Artificial Sequence
  Description of Artificial Sequence: Synthetic polypeptide
QVKLEESGGRLVQPRGSLRLSCAGSGRTFSTYGMAWFRQAPGKEREFVASKASMNYSGRTYYADSVKGRFTIARDNAKNMVFLQMNNLKPEDTAVYYCAAGTGCSTYGCFDAQIIDYWGKGTLVTVSSGGGGSGGGGSGGGGSGGGGSGGGGSQVKLEESGGGLVQAGGSLRLSCAASGGTLSKNTVAWVRQAPGKERGFVTSITCDGRTTYYANSVNGRFPINRNNAENLVVLQMNSLKPDDTALYYCAAYRKSIMSIQPDYWGQGTQVTVSS

SEQ ID NO: 3761 - protein, 259 aa, Artificial Sequence
  Description of Artificial Sequence: Synthetic polypeptide
QVKLEESGGRLVQPRGSLRLSCAGSGRTFSTYGMAWFRQAPGKEREFVASKASMNYSGRTYYADSVKGRFTIARDNAKNMVFLQMNNLKPEDTAVYYCAAGTGCSTYGCFDAQIIDYWGKGTLVTVSSGGGGSGGGGSQVKLEESGGGLVQAGGSLRLSCAASGGTLSKNTVAWVRQAPGKERGFVTSITCDGRTTYYANSVNGRFPINRNNAENLVVLQMNSLKPDDTALYYCAAYRKSIMSIQPDYWGQGTQVTVSS

SEQ ID NO: 3762 - protein, 264 aa, Artificial Sequence; identical to SEQ ID NO: 3759
  Description of Artificial Sequence: Synthetic polypeptide

SEQ ID NO: 3763 - protein, 269 aa, Artificial Sequence
  Description of Artificial Sequence: Synthetic polypeptide
QVKLEESGGRLVQPRGSLRLSCAGSGRTFSTYGMAWFRQAPGKEREFVASKASMNYSGRTYYADSVKGRFTIARDNAKNMVFLQMNNLKPEDTAVYYCAAGTGCSTYGCFDAQIIDYWGKGTLVTVSSGGGGSGGGGSGGGGSGGGGSQVKLEESGGGLVQAGGSLRLSCAASGGTLSKNTVAWVRQAPGKERGFVTSITCDGRTTYYANSVNGRFPINRNNAENLVVLQMNSLKPDDTALYYCAAYRKSIMSIQPDYWGQGTQVTVSS

SEQ ID NO: 3764 - protein, 246 aa, Artificial Sequence
  Description of Artificial Sequence: Synthetic polypeptide
QVKLEESGGGLVQAGGSLRLSCAASGGTLSKNTVAWVRQAPGKERGFVTSITCDGRTTYYANSVNGRFPINRNNAENLVVLQMNSLKPDDTALYYCAAYRKSIMSIQPDYWGQGTQVTVSSGGGGSQVQLVESGGGLVQAGGSLRLSCAASGGTLSKNTVAWFRQAPGKERGFVASITWDGRTTYYADSVKGRFTISRDNAKNTVYLQMNSLKPEDTAVYVCADLGKWPAGPADYWGQGTQVTVSS

SEQ ID NO: 3765 - protein, 256 aa, Artificial Sequence
  Description of Artificial Sequence: Synthetic polypeptide
QVKLEESGGGLVQAGGSLRLSCAASGGTLSKNTVAWVRQAPGKERGFVTSITCDGRTTYYANSVNGRFPINRNNAENLVVLQMNSLKPDDTALYYCAAYRKSIMSIQPDYWGQGTQVTVSSGGGGSGGGGSGGGGSQVQLVESGGGLVQAGGSLRLSCAASGGTLSKNTVAWFRQAPGKERGFVASITWDGRTTYYADSVKGRFTISRDNAKNTVYLQMNSLKPEDTAVYVCADLGKWPAGPADYWGQGTQVTVSS

SEQ ID NO: 3766 - protein, 266 aa, Artificial Sequence
  Description of Artificial Sequence: Synthetic polypeptide
QVKLEESGGGLVQAGGSLRLSCAASGGTLSKNTVAWVRQAPGKERGFVTSITCDGRTTYYANSVNGRFPINRNNAENLVVLQMNSLKPDDTALYYCAAYRKSIMSIQPDYWGQGTQVTVSSGGGGSGGGGSGGGGSGGGGSGGGGSQVQLVESGGGLVQAGGSLRLSCAASGGTLSKNTVAWFRQAPGKERGFVASITWDGRTTYYADSVKGRFTISRDNAKNTVYLQMNSLKPEDTAVYVCADLGKWPAGPADYWGQGTQVTVSS

SEQ ID NO: 3767 - protein, 251 aa, Artificial Sequence
  Description of Artificial Sequence: Synthetic polypeptide
QVKLEESGGGLVQAGGSLRLSCAASGGTLSKNTVAWVRQAPGKERGFVTSITCDGRTTYYANSVNGRFPINRNNAENLVVLQMNSLKPDDTALYYCAAYRKSIMSIQPDYWGQGTQVTVSSGGGGSGGGGSQVQLVESGGGLVQAGGSLRLSCAASGGTLSKNTVAWFRQAPGKERGFVASITWDGRTTYYADSVKGRFTISRDNAKNTVYLQMNSLKPEDTAVYVCADLGKWPAGPADYWGQGTQVTVSS

SEQ ID NO: 3768 - protein, 256 aa, Artificial Sequence; identical to SEQ ID NO: 3765
  Description of Artificial Sequence: Synthetic polypeptide

SEQ ID NO: 3769 - protein, 261 aa, Artificial Sequence
  Description of Artificial Sequence: Synthetic polypeptide
QVKLEESGGGLVQAGGSLRLSCAASGGTLSKNTVAWVRQAPGKERGFVTSITCDGRTTYYANSVNGRFPINRNNAENLVVLQMNSLKPDDTALYYCAAYRKSIMSIQPDYWGQGTQVTVSSGGGGSGGGGSGGGGSGGGGSQVQLVESGGGLVQAGGSLRLSCAASGGTLSKNTVAWFRQAPGKERGFVASITWDGRTTYYADSVKGRFTISRDNAKNTVYLQMNSLKPEDTAVYVCADLGKWPAGPADYWGQGTQVTVSS

SEQ ID NO: 3770 - protein, 245 aa, Artificial Sequence
  Description of Artificial Sequence: Synthetic polypeptide
QVQLVESGGGLVQAGGSLRLSCAASGGTLSKNTVAWFRQAPGKERGFVASITWDGRTTYYADSVKGRFTISRDNAKNTVYLQMNSLKPEDTAVYVCADLGKWPAGPADYWGQGTQVTVSSGGGGSDVQLVESGGGLVQAGGSLRLSCAASGGTLSKNTVAWVRQAPGKERGFVTSITCDGRTTYYANSVKGRFPISRDNAENTVYLQMNSLKPEDTAGYVCADLGKWPAGSADYWGQGTHVTVSS

SEQ ID NO: 3771 - protein, 255 aa, Artificial Sequence
  Description of Artificial Sequence: Synthetic polypeptide
QVQLVESGGGLVQAGGSLRLSCAASGGTLSKNTVAWFRQAPGKERGFVASITWDGRTTYYADSVKGRFTISRDNAKNTVYLQMNSLKPEDTAVYVCADLGKWPAGPADYWGQGTQVTVSSGGGGSGGGGSGGGGSDVQLVESGGGLVQAGGSLRLSCAASGGTLSKNTVAWVRQAPGKERGFVTSITCDGRTTYYANSVKGRFPISRDNAENTVYLQMNSLKPEDTAGYVCADLGKWPAGSADYWGQGTHVTVSS

SEQ ID NO: 3772 - protein, 265 aa, Artificial Sequence
  Description of Artificial Sequence: Synthetic polypeptide
QVQLVESGGGLVQAGGSLRLSCAASGGTLSKNTVAWFRQAPGKERGFVASITWDGRTTYYADSVKGRFTISRDNAKNTVYLQMNSLKPEDTAVYVCADLGKWPAGPADYWGQGTQVTVSSGGGGSGGGGSGGGGSGGGGSGGGGSDVQLVESGGGLVQAGGSLRLSCAASGGTLSKNTVAWVRQAPGKERGFVTSITCDGRTTYYANSVKGRFPISRDNAENTVYLQMNSLKPEDTAGYVCADLGKWPAGSADYWGQGTHVTVSS

SEQ ID NO: 3773 - protein, 250 aa, Artificial Sequence
  Description of Artificial Sequence: Synthetic polypeptide
QVQLVESGGGLVQAGGSLRLSCAASGGTLSKNTVAWFRQAPGKERGFVASITWDGRTTYYADSVKGRFTISRDNAKNTVYLQMNSLKPEDTAVYVCADLGKWPAGPADYWGQGTQVTVSSGGGGSGGGGSDVQLVESGGGLVQAGGSLRLSCAASGGTLSKNTVAWVRQAPGKERGFVTSITCDGRTTYYANSVKGRFPISRDNAENTVYLQMNSLKPEDTAGYVCADLGKWPAGSADYWGQGTHVTVSS

SEQ ID NO: 3774 - protein, 255 aa, Artificial Sequence; identical to SEQ ID NO: 3771
  Description of Artificial Sequence: Synthetic polypeptide

SEQ ID NO: 3775 - protein, 260 aa, Artificial Sequence
  Description of Artificial Sequence: Synthetic polypeptide
QVQLVESGGGLVQAGGSLRLSCAASGGTLSKNTVAWFRQAPGKERGFVASITWDGRTTYYADSVKGRFTISRDNAKNTVYLQMNSLKPEDTAVYVCADLGKWPAGPADYWGQGTQVTVSSGGGGSGGGGSGGGGSGGGGSDVQLVESGGGLVQAGGSLRLSCAASGGTLSKNTVAWVRQAPGKERGFVTSITCDGRTTYYANSVKGRFPISRDNAENTVYLQMNSLKPEDTAGYVCADLGKWPAGSADYWGQGTHVTVSS

SEQ ID NO: 3776 - protein, 42 aa, Artificial Sequence; identical to SEQ ID NO: 3544
  Description of Artificial Sequence: Synthetic polynucleotide
